United States Patent Application Publication US 2019/0038771 A1 - sequence listing, part 3

SEQ ID NO: 65618 - DNA, 22 bp, Artificial Sequence
  chemically synthesized
ttataagtctcaagtatccaca

SEQ ID NO: 65619 - DNA, 22 bp, Artificial Sequence
  chemically synthesized
tataagtctcaagtatccacaa

SEQ ID NO: 65620 - DNA, 22 bp, Artificial Sequence
  chemically synthesized
ataagtctcaagtatccacaaa

SEQ ID NO: 65621 - DNA, 22 bp, Artificial Sequence
  chemically synthesized
taagtctcaagtatccacaaaa

SEQ ID NO: 65622 - DNA, 22 bp, Artificial Sequence
  chemically synthesized
aagtatccacaaaataacacta

SEQ ID NO: 65623 - DNA, 22 bp, Artificial Sequence
  chemically synthesized
caattcttgctcttccttcaga

SEQ ID NO: 65624 - DNA, 22 bp, Artificial Sequence
  chemically synthesized
ttgctcttccttcagacaacct

SEQ ID NO: 65625 - DNA, 22 bp, Artificial Sequence
  chemically synthesized
gctcttccttcagacaacctct

SEQ ID NO: 65626 - DNA, 22 bp, Artificial Sequence
  chemically synthesized
ctcttccttcagacaacctctt

SEQ ID NO: 65627 - DNA, 22 bp, Artificial Sequence
  chemically synthesized
ttccttcagacaacctcttgca

SEQ ID NO: 65628 - DNA, 22 bp, Artificial Sequence
  chemically synthesized
ccttcagacaacctcttgcatg

SEQ ID NO: 65629 - DNA, 22 bp, Artificial Sequence
  chemically synthesized
cttcagacaacctcttgcatga

SEQ ID NO: 65630 - DNA, 22 bp, Artificial Sequence
  chemically synthesized
cagacaacctcttgcatgaacc

SEQ ID NO: 65631 - DNA, 22 bp, Artificial Sequence
  chemically synthesized
agacaacctcttgcatgaacca

SEQ ID NO: 65632 - DNA, 22 bp, Artificial Sequence
  chemically synthesized
ttgcatgaaccacttcagaaag

SEQ ID NO: 65633 - DNA, 22 bp, Artificial Sequence
  chemically synthesized
gcatgaaccacttcagaaagag

SEQ ID NO: 65634 - DNA, 22 bp, Artificial Sequence
  chemically synthesized
catgaaccacttcagaaagaga

SEQ ID NO: 65635 - DNA, 22 bp, Artificial Sequence
  chemically synthesized
cagaaagagaaatatatcatca

SEQ ID NO: 65636 - DNA, 22 bp, Artificial Sequence
  chemically synthesized
agaaagagaaatatatcatcac

SEQ ID NO: 65637 - DNA, 22 bp, Artificial Sequence
  chemically synthesized
gccaggaatcctgactcaagaa

SEQ ID NO: 65638 - DNA, 22 bp, Artificial Sequence
  chemically synthesized
actcaagaacataacctcaaag

SEQ ID NO: 65639 - DNA, 22 bp, Artificial Sequence
  chemically synthesized
aagaacataacctcaaagcagg

SEQ ID NO: 65640 - DNA, 22 bp, Artificial Sequence
  chemically synthesized
aaagcagggtctctaccatggc

SEQ ID NO: 65641 - DNA, 22 bp, Artificial Sequence
  chemically synthesized
taccatggcaattctcaaaatt

SEQ ID NO: 65642 - DNA, 22 bp, Artificial Sequence
  chemically synthesized
ccatggcaattctcaaaattaa

SEQ ID NO: 65643 - DNA, 22 bp, Artificial Sequence
  chemically synthesized
tcaaaattaatacaaatcagaa

SEQ ID NO: 65644 - DNA, 22 bp, Artificial Sequence
  chemically synthesized
aaaattaatacaaatcagaatc

SEQ ID NO: 65645 - DNA, 22 bp, Artificial Sequence
  chemically synthesized
atacaaatcagaatcatgagcg

SEQ ID NO: 65646 - DNA, 22 bp, Artificial Sequence
  chemically synthesized
gtttttaaaaagaaatgcagat

SEQ ID NO: 65647 - DNA, 22 bp, Artificial Sequence
  chemically synthesized
tttttaaaaagaaatgcagatc

SEQ ID NO: 65648 - DNA, 22 bp, Artificial Sequence
  chemically synthesized
ttaaaaagaaatgcagatcatc

SEQ ID NO: 65649 - DNA, 22 bp, Artificial Sequence
  chemically synthesized
taaaaagaaatgcagatcatca

SEQ ID NO: 65650 - DNA, 22 bp, Artificial Sequence
  chemically synthesized
aaaaagaaatgcagatcatcag

SEQ ID NO: 65651 - DNA, 22 bp, Artificial Sequence
  chemically synthesized
aaaagaaatgcagatcatcagg

SEQ ID NO: 65652 - DNA, 22 bp, Artificial Sequence
  chemically synthesized
gctgtttgggaaggaatccaga

SEQ ID NO: 65653 - DNA, 22 bp, Artificial Sequence
  chemically synthesized
tttgggaaggaatccagaaatt

SEQ ID NO: 65654 - DNA, 22 bp, Artificial Sequence
  chemically synthesized
gggaaggaatccagaaattgca

SEQ ID NO: 65655 - DNA, 22 bp, Artificial Sequence
  chemically synthesized
ggaaggaatccagaaattgcat

SEQ ID NO: 65656 - DNA, 22 bp, Artificial Sequence
  chemically synthesized
catttttaaacattcagtgatt

SEQ ID NO: 65657 - DNA, 22 bp, Artificial Sequence
  chemically synthesized
ttaaacattcagtgattctaaa

SEQ ID NO: 65658 - DNA, 22 bp, Artificial Sequence
  chemically synthesized
taaacattcagtgattctaaaa

SEQ ID NO: 65659 - DNA, 22 bp, Artificial Sequence
  chemically synthesized
aaacattcagtgattctaaaat

SEQ ID NO: 65660 - DNA, 22 bp, Artificial Sequence
  chemically synthesized
aacattcagtgattctaaaatg

SEQ ID NO: 65661 - DNA, 22 bp, Artificial Sequence
  chemically synthesized
agtgattctaaaatgagtgaat

SEQ ID NO: 65662 - DNA, 22 bp, Artificial Sequence
  chemically synthesized
taaaatgagtgaatattttgag

SEQ ID NO: 65663 - DNA, 22 bp, Artificial Sequence
  chemically synthesized
aaatgagtgaatattttgagaa

SEQ ID NO: 65664 - DNA, 22 bp, Artificial Sequence
  chemically synthesized
tgagaaacattggtctcctact

SEQ ID NO: 65665 - DNA, 22 bp, Artificial Sequence
  chemically synthesized
gagaaacattggtctcctactt

SEQ ID NO: 65666 - DNA, 22 bp, Artificial Sequence
  chemically synthesized
agaaacattggtctcctactta

SEQ ID NO: 65667 - DNA, 22 bp, Artificial Sequence
  chemically synthesized
gtctcctacttaggccaatcta

SEQ ID NO: 65668 - DNA, 22 bp, Artificial Sequence
  chemically synthesized
ctacttaggccaatctagttca

SEQ ID NO: 65669 - DNA, 22 bp, Artificial Sequence
  chemically synthesized
cttaggccaatctagttcagga

SEQ ID NO: 65670 - DNA, 22 bp, Artificial Sequence
  chemically synthesized
aggccaatctagttcaggaaat

SEQ ID NO: 65671 - DNA, 22 bp, Artificial Sequence
  chemically synthesized
ggccaatctagttcaggaaatg

SEQ ID NO: 65672 - DNA, 22 bp, Artificial Sequence
  chemically synthesized
gttcaggaaatgcctggcaata

SEQ ID NO: 65673 - DNA, 22 bp, Artificial Sequence
  chemically synthesized
aggaaatgcctggcaatacttg

SEQ ID NO: 65674 - DNA, 22 bp, Artificial Sequence
  chemically synthesized
gcaatacttgttaatacctggg

SEQ ID NO: 65675 - DNA, 22 bp, Artificial Sequence
  chemically synthesized
gttaatacctgggaaaccatac

SEQ ID NO: 65676 - DNA, 22 bp, Artificial Sequence
  chemically synthesized
ttaatacctgggaaaccataca

SEQ ID NO: 65677 - DNA, 22 bp, Artificial Sequence
  chemically synthesized
atacctgggaaaccatacattt

SEQ ID NO: 65678 - DNA, 22 bp, Artificial Sequence
  chemically synthesized
ggaaaccatacatttcctccca

SEQ ID NO: 65679 - DNA, 22 bp, Artificial Sequence
  chemically synthesized
cctcccaccctattatgttcct

SEQ ID NO: 65680 - DNA, 22 bp, Artificial Sequence
  chemically synthesized
ctcccaccctattatgttcctg

SEQ ID NO: 65681 - DNA, 22 bp, Artificial Sequence
  chemically synthesized
ccaccctattatgttcctgatt

SEQ ID NO: 65682 - DNA, 22 bp, Artificial Sequence
  chemically synthesized
ttatgttcctgattatttttct

SEQ ID NO: 65683 - DNA, 22 bp, Artificial Sequence
  chemically synthesized
tgttcctgattatttttctcac

SEQ ID NO: 65684 - DNA, 22 bp, Artificial Sequence
  chemically synthesized
ctgattatttttctcacctgaa

SEQ ID NO: 65685 - DNA, 22 bp, Artificial Sequence
  chemically synthesized
attatttttctcacctgaacta

SEQ ID NO: 65686 - DNA, 22 bp, Artificial Sequence
  chemically synthesized
tttttctcacctgaactaccag

SEQ ID NO: 65687 - DNA, 22 bp, Artificial Sequence
  chemically synthesized
ttctcacctgaactaccagtat

SEQ ID NO: 65688 - DNA, 22 bp, Artificial Sequence
  chemically synthesized
tctcacctgaactaccagtatt

SEQ ID NO: 65689 - DNA, 22 bp, Artificial Sequence
  chemically synthesized
ctcacctgaactaccagtattc

SEQ ID NO: 65690 - DNA, 22 bp, Artificial Sequence
  chemically synthesized
tcacctgaactaccagtattca

SEQ ID NO: 65691 - DNA, 22 bp, Artificial Sequence
  chemically synthesized
acctgaactaccagtattcatt

SEQ ID NO: 65692 - DNA, 22 bp, Artificial Sequence
  chemically synthesized
aactaccagtattcatttccaa

SEQ ID NO: 65693 - DNA, 22 bp, Artificial Sequence
  chemically synthesized
ccagtattcatttccaagagtc

SEQ ID NO: 65694 - DNA, 22 bp, Artificial Sequence
  chemically synthesized
atttccaagagtctcacacctt

SEQ ID NO: 65695 - DNA, 22 bp, Artificial Sequence
  chemically synthesized
ccaagagtctcacaccttacct

SEQ ID NO: 65696 - DNA, 22 bp, Artificial Sequence
  chemically synthesized
caagagtctcacaccttacctt

SEQ ID NO: 65697 - DNA, 22 bp, Artificial Sequence
  chemically synthesized
acaccttaccttctgctgattt

SEQ ID NO: 65698 - DNA, 22 bp, Artificial Sequence
  chemically synthesized
accttctgctgatttgtacaca

SEQ ID NO: 65699 - DNA, 22 bp, Artificial Sequence
  chemically synthesized
ccttctgctgatttgtacacat

SEQ ID NO: 65700 - DNA, 22 bp, Artificial Sequence
  chemically synthesized
ctgctgatttgtacacattcat

SEQ ID NO: 65701 - DNA, 22 bp, Artificial Sequence
  chemically synthesized
tgctgatttgtacacattcatt

SEQ ID NO: 65702 - DNA, 22 bp, Artificial Sequence
  chemically synthesized
ctgatttgtacacattcattca

SEQ ID NO: 65703 - DNA, 22 bp, Artificial Sequence
  chemically synthesized
atttgtacacattcattcaaga

SEQ ID NO: 65704 - DNA, 22 bp, Artificial Sequence
  chemically synthesized
gtacacattcattcaagaagca

SEQ ID NO: 65705 - DNA, 22 bp, Artificial Sequence
  chemically synthesized
tacacattcattcaagaagcac

SEQ ID NO: 65706 - DNA, 22 bp, Artificial Sequence
  chemically synthesized
attcaagaagcactccttaaac

SEQ ID NO: 65707 - DNA, 22 bp, Artificial Sequence
  chemically synthesized
aagaagcactccttaaaccttt

SEQ ID NO: 65708 - DNA, 22 bp, Artificial Sequence
  chemically synthesized
cttaaacctttcctctgacaat

SEQ ID NO: 65709 - DNA, 22 bp, Artificial Sequence
  chemically synthesized
aaacctttcctctgacaatagc

SEQ ID NO: 65710 - DNA, 22 bp, Artificial Sequence
  chemically synthesized
aacctttcctctgacaatagca

SEQ ID NO: 65711 - DNA, 22 bp, Artificial Sequence
  chemically synthesized
tcctctgacaatagcattcatt

SEQ ID NO: 65712 - DNA, 22 bp, Artificial Sequence
  chemically synthesized
cctctgacaatagcattcattt

SEQ ID NO: 65713 - DNA, 22 bp, Artificial Sequence
  chemically synthesized
ctctgacaatagcattcattta

SEQ ID NO: 65714 - DNA, 22 bp, Artificial Sequence
  chemically synthesized
tgacaatagcattcatttatag

SEQ ID NO: 65715 - DNA, 22 bp, Artificial Sequence
  chemically synthesized
acaatagcattcatttatagta

SEQ ID NO: 65716 - DNA, 22 bp, Artificial Sequence
  chemically synthesized
atttatagtaattcagatattt

SEQ ID NO: 65717 - DNA, 22 bp, Artificial Sequence
  chemically synthesized
atagtaattcagatattttgca

SEQ ID NO: 65718 - DNA, 22 bp, Artificial Sequence
  chemically synthesized
tagtaattcagatattttgcat

SEQ ID NO: 65719 - DNA, 22 bp, Artificial Sequence
  chemically synthesized
agatattttgcatctttctatg

SEQ ID NO: 65720 - DNA, 22 bp, Artificial Sequence
  chemically synthesized
tgcatctttctatgaaccttca

SEQ ID NO: 65721 - DNA, 22 bp, Artificial Sequence
  chemically synthesized
gcatctttctatgaaccttcag

SEQ ID NO: 65722 - DNA, 22 bp, Artificial Sequence
  chemically synthesized
catctttctatgaaccttcagt

SEQ ID NO: 65723 - DNA, 22 bp, Artificial Sequence
  chemically synthesized
tctatgaaccttcagtggccct

SEQ ID NO: 65724 - DNA, 22 bp, Artificial Sequence
  chemically synthesized
ctatgaaccttcagtggcccta

SEQ ID NO: 65725 - DNA, 22 bp, Artificial Sequence
  chemically synthesized
tatgaaccttcagtggccctaa

SEQ ID NO: 65726 - DNA, 22 bp, Artificial Sequence
  chemically synthesized
tgaaccttcagtggccctaaac

SEQ ID NO: 65727 - DNA, 22 bp, Artificial Sequence
  chemically synthesized
cagtggccctaaacttggcctc

SEQ ID NO: 65728 - DNA, 22 bp, Artificial Sequence
  chemically synthesized
agtggccctaaacttggcctct

SEQ ID NO: 65729 - DNA, 22 bp, Artificial Sequence
  chemically synthesized
aacttggcctcttgtacctttt

SEQ ID NO: 65730 - DNA, 22 bp, Artificial Sequence
  chemically synthesized
ggcctcttgtaccttttttatt

SEQ ID NO: 65731 - DNA, 22 bp, Artificial Sequence
  chemically synthesized
gcctcttgtaccttttttattt

SEQ ID NO: 65732 - DNA, 22 bp, Artificial Sequence
  chemically synthesized
ttgtaccttttttattttcata

SEQ ID NO: 65733 - DNA, 22 bp, Artificial Sequence
  chemically synthesized
gtaccttttttattttcataca

SEQ ID NO: 65734 - DNA, 22 bp, Artificial Sequence
  chemically synthesized
taccttttttattttcatacat

SEQ ID NO: 65735 - DNA, 22 bp, Artificial Sequence
  chemically synthesized
ttttattttcatacattaaaaa

SEQ ID NO: 65736 - DNA, 22 bp, Artificial Sequence
  chemically synthesized
tttattttcatacattaaaaaa

SEQ ID NO: 65737 - DNA, 22 bp, Artificial Sequence
  chemically synthesized
ttattttcatacattaaaaaaa

SEQ ID NO: 65738 - DNA, 22 bp, Artificial Sequence
  chemically synthesized
tattttcatacattaaaaaaaa

SEQ ID NO: 65739 - DNA, 22 bp, Artificial Sequence
  chemically synthesized
attttcatacattaaaaaaaaa

SEQ ID NO: 65740 - DNA, 22 bp, Artificial Sequence
  chemically synthesized
ttttcatacattaaaaaaaaat

SEQ ID NO: 65741 - DNA, 22 bp, Artificial Sequence
  chemically synthesized
tcatacattaaaaaaaaattga

SEQ ID NO: 65742 - DNA, 22 bp, Artificial Sequence
  chemically synthesized
catacattaaaaaaaaattgat

SEQ ID NO: 65743 - DNA, 22 bp, Artificial Sequence
  chemically synthesized
atacattaaaaaaaaattgatg

SEQ ID NO: 65744 - DNA, 22 bp, Artificial Sequence
  chemically synthesized
aaaaaaaattgatgtagctttg

SEQ ID NO: 65745 - DNA, 22 bp, Artificial Sequence
  chemically synthesized
atgtagctttgctcattccatc

SEQ ID NO: 65746 - DNA, 22 bp, Artificial Sequence
  chemically synthesized
tgctcattccatcccctcatca

SEQ ID NO: 65747 - DNA, 22 bp, Artificial Sequence
  chemically synthesized
gctcattccatcccctcatcac

SEQ ID NO: 65748 - DNA, 22 bp, Artificial Sequence
  chemically synthesized
ctcattccatcccctcatcacc

SEQ ID NO: 65749 - DNA, 22 bp, Artificial Sequence
  chemically synthesized
attccatcccctcatcacctgg

SEQ ID NO: 65750 - DNA, 22 bp, Artificial Sequence
  chemically synthesized
catcccctcatcacctggaagg

SEQ ID NO: 65751 - DNA, 22 bp, Artificial Sequence
  chemically synthesized
atcacctggaaggaaaaaaagc

SEQ ID NO: 65752 - DNA, 22 bp, Artificial Sequence
  chemically synthesized
gaaggaaaaaaagctcaagcac

SEQ ID NO: 65753 - DNA, 22 bp, Artificial Sequence
  chemically synthesized
aagcacttctagttagaaacat

SEQ ID NO: 65754 - DNA, 22 bp, Artificial Sequence
  chemically synthesized
ctagttagaaacataaaaatgt

SEQ ID NO: 65755 - DNA, 22 bp, Artificial Sequence
  chemically synthesized
tagttagaaacataaaaatgta

SEQ ID NO: 65756 - DNA, 22 bp, Artificial Sequence
  chemically synthesized
gttagaaacataaaaatgtaat

SEQ ID NO: 65757 - DNA, 22 bp, Artificial Sequence
  chemically synthesized
gaaacataaaaatgtaataaat

SEQ ID NO: 65758 - DNA, 22 bp, Artificial Sequence
  chemically synthesized
tggctcaaggcatgaaaagtat

SEQ ID NO: 65759 - DNA, 22 bp, Artificial Sequence
  chemically synthesized
ggctcaaggcatgaaaagtatg

SEQ ID NO: 65760 - DNA, 22 bp, Artificial Sequence
  chemically synthesized
gctcaaggcatgaaaagtatga

SEQ ID NO: 65761 - DNA, 22 bp, Artificial Sequence
  chemically synthesized
aaggcatgaaaagtatgagtgt

SEQ ID NO: 65762 - DNA, 22 bp, Artificial Sequence
  chemically synthesized
ccttgctcagcaggctgcctgg

SEQ ID NO: 65763 - DNA, 22 bp, Artificial Sequence
  chemically synthesized
gctcagcaggctgcctggccaa

SEQ ID NO: 65764 - DNA, 22 bp, Artificial Sequence
  chemically synthesized
ctcagcaggctgcctggccaaa

SEQ ID NO: 65765 - DNA, 22 bp, Artificial Sequence
  chemically synthesized
agcaggctgcctggccaaagtg

SEQ ID NO: 65766 - DNA, 22 bp, Artificial Sequence
  chemically synthesized
cctggccaaagtgttgagatgt

SEQ ID NO: 65767 - DNA, 22 bp, Artificial Sequence
  chemically synthesized
gccaaagtgttgagatgtctgc

SEQ ID NO: 65768 - DNA, 22 bp, Artificial Sequence
  chemically synthesized
agatgtctgcaatttggttgat

SEQ ID NO: 65769 - DNA, 22 bp, Artificial Sequence
  chemically synthesized
caatttggttgatattactcaa

SEQ ID NO: 65770 - DNA, 22 bp, Artificial Sequence
  chemically synthesized
ggttgatattactcaataccaa

SEQ ID NO: 65771 - DNA, 22 bp, Artificial Sequence
  chemically synthesized
gttgatattactcaataccaaa

SEQ ID NO: 65772 - DNA, 22 bp, Artificial Sequence
  chemically synthesized
atattactcaataccaaagaga

SEQ ID NO: 65773 - DNA, 22 bp, Artificial Sequence
  chemically synthesized
ctcaataccaaagagaaggcaa

SEQ ID NO: 65774 - DNA, 22 bp, Artificial Sequence
  chemically synthesized
aataccaaagagaaggcaaagt

SEQ ID NO: 65775 - DNA, 22 bp, Artificial Sequence
  chemically synthesized
tctgctctctccttgccctctt

SEQ ID NO: 65776 - DNA, 22 bp, Artificial Sequence
  chemically synthesized
tgctctctccttgccctcttgt

SEQ ID NO: 65777 - DNA, 22 bp, Artificial Sequence
  chemically synthesized
ctctctccttgccctcttgttt

SEQ ID NO: 65778 - DNA, 22 bp, Artificial Sequence
  chemically synthesized
tctccttgccctcttgtttctc

SEQ ID NO: 65779 - DNA, 22 bp, Artificial Sequence
  chemically synthesized
tccttgccctcttgtttctcag

SEQ ID NO: 65780 - DNA, 22 bp, Artificial Sequence
  chemically synthesized
cttgccctcttgtttctcagaa

SEQ ID NO: 65781 - DNA, 22 bp, Artificial Sequence
  chemically synthesized
gccctcttgtttctcagaacat

SEQ ID NO: 65782 - DNA, 22 bp, Artificial Sequence
  chemically synthesized
ccctcttgtttctcagaacatg

SEQ ID NO: 65783 - DNA, 22 bp, Artificial Sequence
  chemically synthesized
ttgtttctcagaacatgctgct

SEQ ID NO: 65784 - DNA, 22 bp, Artificial Sequence
  chemically synthesized
gtttctcagaacatgctgctga

SEQ ID NO: 65785 - DNA, 22 bp, Artificial Sequence
  chemically synthesized
tttctcagaacatgctgctgag

SEQ ID NO: 65786 - DNA, 22 bp, Artificial Sequence
  chemically synthesized
ctcagaacatgctgctgagctg

SEQ ID NO: 65787 - DNA, 22 bp, Artificial Sequence
  chemically synthesized
tcagaacatgctgctgagctgt

SEQ ID NO: 65788 - DNA, 22 bp, Artificial Sequence
  chemically synthesized
agaacatgctgctgagctgttt

SEQ ID NO: 65789 - DNA, 22 bp, Artificial Sequence
  chemically synthesized
ctgagctgtttatcagcttcca

SEQ ID NO: 65790 - DNA, 22 bp, Artificial Sequence
  chemically synthesized
agctgtttatcagcttccactg

SEQ ID NO: 65791 - DNA, 22 bp, Artificial Sequence
  chemically synthesized
tttatcagcttccactgtcctt

SEQ ID NO: 65792 - DNA, 22 bp, Artificial Sequence
  chemically synthesized
atcagcttccactgtccttccc

SEQ ID NO: 65793 - DNA, 22 bp, Artificial Sequence
  chemically synthesized
tcagcttccactgtccttccca

SEQ ID NO: 65794 - DNA, 22 bp, Artificial Sequence
  chemically synthesized
ccactgtccttcccagcctccc

SEQ ID NO: 65795 - DNA, 22 bp, Artificial Sequence
  chemically synthesized
cactgtccttcccagcctcccc

SEQ ID NO: 65796 - DNA, 22 bp, Artificial Sequence
  chemically synthesized
tccttcccagcctcccccacca

SEQ ID NO: 65797 - DNA, 22 bp, Artificial Sequence
  chemically synthesized
cccagcctcccccaccatggag

SEQ ID NO: 65798 - DNA, 22 bp, Artificial Sequence
  chemically synthesized
ccagcctcccccaccatggagg

SEQ ID NO: 65799 - DNA, 22 bp, Artificial Sequence
  chemically synthesized
ccccaccatggagggctaacca

SEQ ID NO: 65800 - DNA, 22 bp, Artificial Sequence
  chemically synthesized
accacaaatgatggcagccaat

SEQ ID NO: 65801 - DNA, 22 bp, Artificial Sequence
  chemically synthesized
cagctgccacctggctctttag

SEQ ID NO: 65802 - DNA, 22 bp, Artificial Sequence
  chemically synthesized
ccacctggctctttaggaagct

SEQ ID NO: 65803 - DNA, 22 bp, Artificial Sequence
  chemically synthesized
gctctttaggaagcttagctca

SEQ ID NO: 65804 - DNA, 22 bp, Artificial Sequence
  chemically synthesized
tttaggaagcttagctcagggg

SEQ ID NO: 65805 - DNA, 22 bp, Artificial Sequence
  chemically synthesized
taggaagcttagctcagggggg

SEQ ID NO: 65806 - DNA, 22 bp, Artificial Sequence
  chemically synthesized
aggaagcttagctcaggggggc

SEQ ID NO: 65807 - DNA, 22 bp, Artificial Sequence
  chemically synthesized
ggaagcttagctcaggggggcc

SEQ ID NO: 65808 - DNA, 22 bp, Artificial Sequence
  chemically synthesized
agctcaggggggcctgagtgta

SEQ ID NO: 65809 - DNA, 22 bp, Artificial Sequence
  chemically synthesized
gctcaggggggcctgagtgtag

SEQ ID NO: 65810 - DNA, 22 bp, Artificial Sequence
  chemically synthesized
aggggggcctgagtgtagaacc

SEQ ID NO: 65811 - DNA, 22 bp, Artificial Sequence
  chemically synthesized
agtgtagaaccatgtgcgagag

SEQ ID NO: 65812 - DNA, 22 bp, Artificial Sequence
  chemically synthesized
gctggggcactggctgccagtt

SEQ ID NO: 65813 - DNA, 22 bp, Artificial Sequence
  chemically synthesized
ctggggcactggctgccagttc

SEQ ID NO: 65814 - DNA, 22 bp, Artificial Sequence
  chemically synthesized
gggcactggctgccagttccct

SEQ ID NO: 65815 - DNA, 22 bp, Artificial Sequence
  chemically synthesized
gctgccagttccctccctgaga

SEQ ID NO: 65816 - DNA, 22 bp, Artificial Sequence
  chemically synthesized
ccagttccctccctgagaatgt

SEQ ID NO: 65817 - DNA, 22 bp, Artificial Sequence
  chemically synthesized
cctccctgagaatgtttgggtt

SEQ ID NO: 65818 - DNA, 22 bp, Artificial Sequence
  chemically synthesized
cctgagaatgtttgggttggaa

SEQ ID NO: 65819 - DNA, 22 bp, Artificial Sequence
  chemically synthesized
agaatgtttgggttggaaatgg

SEQ ID NO: 65820 - DNA, 22 bp, Artificial Sequence
  chemically synthesized
gggttggaaatggtcttgtcag

SEQ ID NO: 65821 - DNA, 22 bp, Artificial Sequence
  chemically synthesized
ggttggaaatggtcttgtcagt

SEQ ID NO: 65822 - DNA, 22 bp, Artificial Sequence
  chemically synthesized
gaaatggtcttgtcagtcagta

SEQ ID NO: 65823 - DNA, 22 bp, Artificial Sequence
  chemically synthesized
gtcagtcagtataagccccagc

SEQ ID NO: 65824 - DNA, 22 bp, Artificial Sequence
  chemically synthesized
tcagtcagtataagccccagct

SEQ ID NO: 65825 - DNA, 22 bp, Artificial Sequence
  chemically synthesized
ttgccagggttctatatctctg

SEQ ID NO: 65826 - DNA, 22 bp, Artificial Sequence
  chemically synthesized
tgccagggttctatatctctgt

SEQ ID NO: 65827 - DNA, 22 bp, Artificial Sequence
  chemically synthesized
gccagggttctatatctctgtg

SEQ ID NO: 65828 - DNA, 22 bp, Artificial Sequence
  chemically synthesized
ccagggttctatatctctgtgc

SEQ ID NO: 65829 - DNA, 22 bp, Artificial Sequence
  chemically synthesized
tatatctctgtgcctcagttcc

SEQ ID NO: 65830 - DNA, 22 bp, Artificial Sequence
  chemically synthesized
tatctctgtgcctcagttccac

SEQ ID NO: 65831 - DNA, 22 bp, Artificial Sequence
  chemically synthesized
tgtgcctcagttccacatctgt

SEQ ID NO: 65832 - DNA, 22 bp, Artificial Sequence
  chemically synthesized
tgcctcagttccacatctgtaa

SEQ ID NO: 65833 - DNA, 22 bp, Artificial Sequence
  chemically synthesized
agttccacatctgtaaaaagga

SEQ ID NO: 65834 - DNA, 22 bp, Artificial Sequence
  chemically synthesized
cacatctgtaaaaaggaaaggc

SEQ ID NO: 65835 - DNA, 22 bp, Artificial Sequence
  chemically synthesized
taaaaaggaaaggctagtagta

SEQ ID NO: 65836 - DNA, 22 bp, Artificial Sequence
  chemically synthesized
gtagtatatacctcaaagagtc

SEQ ID NO: 65837 - DNA, 22 bp, Artificial Sequence
  chemically synthesized
aaagagtcaataatgttataca

SEQ ID NO: 65838 - DNA, 22 bp, Artificial Sequence
  chemically synthesized
tacaatgacagttattatagga

SEQ ID NO: 65839 - DNA, 22 bp, Artificial Sequence
  chemically synthesized
ttataggaaaatacttgaaacg

SEQ ID NO: 65840 - DNA, 22 bp, Artificial Sequence
  chemically synthesized
taggaaaatacttgaaacgatg

SEQ ID NO: 65841 - DNA, 22 bp, Artificial Sequence
  chemically synthesized
gaaacgatgtctgcctctttgt

SEQ ID NO: 65842 - DNA, 22 bp, Artificial Sequence
  chemically synthesized
aaacgatgtctgcctctttgta

SEQ ID NO: 65843 - DNA, 22 bp, Artificial Sequence
  chemically synthesized
cctctttgtagatgttcatcag

SEQ ID NO: 65844 - DNA, 22 bp, Artificial Sequence
  chemically synthesized
tttgtagatgttcatcagatat

SEQ ID NO: 65845 - DNA, 22 bp, Artificial Sequence
  chemically synthesized
tgtagatgttcatcagatatta

SEQ ID NO: 65846 - DNA, 22 bp, Artificial Sequence
  chemically synthesized
gtagatgttcatcagatattaa

SEQ ID NO: 65847 - DNA, 22 bp, Artificial Sequence
  chemically synthesized
tagatgttcatcagatattaac

SEQ ID NO: 65848 - DNA, 22 bp, Artificial Sequence
  chemically synthesized
atcagatattaacaacactatg

SEQ ID NO: 65849 - DNA, 22 bp, Artificial Sequence
  chemically synthesized
acaacactatggaattttttta

SEQ ID NO: 65850 - DNA, 22 bp, Artificial Sequence
  chemically synthesized
tggaatttttttattattatct

SEQ ID NO: 65851 - DNA, 22 bp, Artificial Sequence
  chemically synthesized
ttttattattatcttgaaatgt

SEQ ID NO: 65852 - DNA, 22 bp, Artificial Sequence
  chemically synthesized
tttattattatcttgaaatgtt

SEQ ID NO: 65853 - DNA, 22 bp, Artificial Sequence
  chemically synthesized
ttattattatcttgaaatgtta

SEQ ID NO: 65854 - DNA, 22 bp, Artificial Sequence
  chemically synthesized
tattattatcttgaaatgttat

SEQ ID NO: 65855 - DNA, 22 bp, Artificial Sequence
  chemically synthesized
attattatcttgaaatgttatc

SEQ ID NO: 65856 - DNA, 22 bp, Artificial Sequence
  chemically synthesized
ttattatcttgaaatgttatcc

SEQ ID NO: 65857 - DNA, 22 bp, Artificial Sequence
  chemically synthesized
ttatcttgaaatgttatccaaa

SEQ ID NO: 65858 - DNA, 22 bp, Artificial Sequence
  chemically synthesized
tcttgaaatgttatccaaacaa

SEQ ID NO: 65859 - DNA, 22 bp, Artificial Sequence
  chemically synthesized
gaaatgttatccaaacaatctc

SEQ ID NO: 65860 - DNA, 22 bp, Artificial Sequence
  chemically synthesized
aaatgttatccaaacaatctca

SEQ ID NO: 65861 - DNA, 22 bp, Artificial Sequence
  chemically synthesized
tccaaacaatctcagaaccttt

SEQ ID NO: 65862 - DNA, 22 bp, Artificial Sequence
  chemically synthesized
agaacctttcaacctggtcaaa

SEQ ID NO: 65863 - DNA, 22 bp, Artificial Sequence
  chemically synthesized
tcaacctggtcaaatcttgctg

SEQ ID NO: 65864 - DNA, 22 bp, Artificial Sequence
  chemically synthesized
caacctggtcaaatcttgctga

SEQ ID NO: 65865 - DNA, 22 bp, Artificial Sequence
  chemically synthesized
aacctggtcaaatcttgctgag

SEQ ID NO: 65866 - DNA, 22 bp, Artificial Sequence
  chemically synthesized
gtcaaatcttgctgaggaaggt

SEQ ID NO: 65867 - DNA, 22 bp, Artificial Sequence
  chemically synthesized
gctgaggaaggttgatgctcct

SEQ ID NO: 65868 - DNA, 22 bp, Artificial Sequence
  chemically synthesized
ctgaggaaggttgatgctcctt

SEQ ID NO: 65869 - DNA, 22 bp, Artificial Sequence
  chemically synthesized
aggaaggttgatgctccttgta

SEQ ID NO: 65870 - DNA, 22 bp, Artificial Sequence
  chemically synthesized
atgctccttgtaactactgtaa

SEQ ID NO: 65871 - DNA, 22 bp, Artificial Sequence
  chemically synthesized
cttgtaactactgtaagtttaa

SEQ ID NO: 65872 - DNA, 22 bp, Artificial Sequence
  chemically synthesized
gtaactactgtaagtttaaaca

SEQ ID NO: 65873 - DNA, 22 bp, Artificial Sequence
  chemically synthesized
taactactgtaagtttaaacat

SEQ ID NO: 65874 - DNA, 22 bp, Artificial Sequence
  chemically synthesized
ctgtaagtttaaacattactcg

SEQ ID NO: 65875 - DNA, 22 bp, Artificial Sequence
  chemically synthesized
taagtttaaacattactcgagt

SEQ ID NO: 65876 - DNA, 22 bp, Artificial Sequence
  chemically synthesized
aaacattactcgagtatggaca

SEQ ID NO: 65877 - DNA, 22 bp, Artificial Sequence
  chemically synthesized
aacattactcgagtatggacat

SEQ ID NO: 65878 - DNA, 22 bp, Artificial Sequence
  chemically synthesized
ctcgagtatggacatcaacaga

SEQ ID NO: 65879 - DNA, 22 bp, Artificial Sequence
  chemically synthesized
gagtatggacatcaacagacct

SEQ ID NO: 65880 - DNA, 22 bp, Artificial Sequence
  chemically synthesized
gatttaaatcttgactcaggcc

SEQ ID NO: 65881 - DNA, 22 bp, Artificial Sequence
  chemically synthesized
aaatcttgactcaggcctttga

SEQ ID NO: 65882 - DNA, 22 bp, Artificial Sequence
  chemically synthesized
aatcttgactcaggcctttgat

SEQ ID NO: 65883 - DNA, 22 bp, Artificial Sequence
  chemically synthesized
gactcaggcctttgattcatta

SEQ ID NO: 65884 - DNA, 22 bp, Artificial Sequence
  chemically synthesized
actcaggcctttgattcattac

SEQ ID NO: 65885 - DNA, 22 bp, Artificial Sequence
  chemically synthesized
aggcctttgattcattacttaa

SEQ ID NO: 65886 - DNA, 22 bp, Artificial Sequence
  chemically synthesized
tgattcattacttaaactttag

SEQ ID NO: 65887 - DNA, 22 bp, Artificial Sequence
  chemically synthesized
gattcattacttaaactttagg

SEQ ID NO: 65888 - DNA, 22 bp, Artificial Sequence
  chemically synthesized
attcattacttaaactttagga

SEQ ID NO: 65889 - DNA, 22 bp, Artificial Sequence
  chemically synthesized
attacttaaactttaggaactt

SEQ ID NO: 65890 - DNA, 22 bp, Artificial Sequence
  chemically synthesized
cttaaactttaggaacttcaat

SEQ ID NO: 65891 - DNA, 22 bp, Artificial Sequence
  chemically synthesized
aaactttaggaacttcaatctc

SEQ ID NO: 65892 - DNA, 22 bp, Artificial Sequence
  chemically synthesized
aactttaggaacttcaatctca

SEQ ID NO: 65893 - DNA, 22 bp, Artificial Sequence
  chemically synthesized
taggaacttcaatctcatcacc

SEQ ID NO: 65894 - DNA, 22 bp, Artificial Sequence
  chemically synthesized
aggaacttcaatctcatcacct

SEQ ID NO: 65895 - DNA, 22 bp, Artificial Sequence
  chemically synthesized
ggaacttcaatctcatcacctg

SEQ ID NO: 65896 - DNA, 22 bp, Artificial Sequence
  chemically synthesized
caatctcatcacctgcaaccta

SEQ ID NO: 65897 - DNA, 22 bp, Artificial Sequence
  chemically synthesized
aatctcatcacctgcaacctaa

SEQ ID NO: 65898 - DNA, 22 bp, Artificial Sequence
  chemically synthesized
atcacctgcaacctaagattaa

SEQ ID NO: 65899 - DNA, 22 bp, Artificial Sequence
  chemically synthesized
caacctaagattaataatatta

SEQ ID NO: 65900 - DNA, 22 bp, Artificial Sequence
  chemically synthesized
agattaataatattagtcccca

SEQ ID NO: 65901 - DNA, 22 bp, Artificial Sequence
  chemically synthesized
ataatattagtccccattattg

SEQ ID NO: 65902 - DNA, 22 bp, Artificial Sequence
  chemically synthesized
gtccccattattgagagcaatg

SEQ ID NO: 65903 - DNA, 22 bp, Artificial Sequence
  chemically synthesized
ttgagagcaatgggctaggctt

SEQ ID NO: 65904 - DNA, 22 bp, Artificial Sequence
  chemically synthesized
agagcaatgggctaggcttgta

SEQ ID NO: 65905 - DNA, 22 bp, Artificial Sequence
  chemically synthesized
ggcttgtaagtgttttatgtgt

SEQ ID NO: 65906 - DNA, 22 bp, Artificial Sequence
  chemically synthesized
gtaagtgttttatgtgtcattt

SEQ ID NO: 65907 - DNA, 22 bp, Artificial Sequence
  chemically synthesized
taagtgttttatgtgtcattta

SEQ ID NO: 65908 - DNA, 22 bp, Artificial Sequence
  chemically synthesized
tatgtgtcatttaattttcaca

SEQ ID NO: 65909 - DNA, 22 bp, Artificial Sequence
  chemically synthesized
atgtgtcatttaattttcacaa

SEQ ID NO: 65910 - DNA, 22 bp, Artificial Sequence
  chemically synthesized
tgtgtcatttaattttcacaac

SEQ ID NO: 65911 - DNA, 22 bp, Artificial Sequence
  chemically synthesized
aattttcacaacagtcatacgc

SEQ ID NO: 65912 - DNA, 22 bp, Artificial Sequence
  chemically synthesized
attttcacaacagtcatacgca

SEQ ID NO: 65913 - DNA, 22 bp, Artificial Sequence
  chemically synthesized
tcacaacagtcatacgcatttg

SEQ ID NO: 65914 - DNA, 22 bp, Artificial Sequence
  chemically synthesized
cacaacagtcatacgcatttga

SEQ ID NO: 65915 - DNA, 22 bp, Artificial Sequence
  chemically synthesized
acaacagtcatacgcatttgat

SEQ ID NO: 65916 - DNA, 22 bp, Artificial Sequence
  chemically synthesized
gataatattatgtctaaaaaga

SEQ ID NO: 65917 - DNA, 22 bp, Artificial Sequence
  chemically synthesized
ataatattatgtctaaaaagaa

SEQ ID NO: 65918 - DNA, 22 bp, Artificial Sequence
  chemically synthesized
tgtctaaaaagaagcaacagaa

SEQ ID NO: 65919 - DNA, 22 bp, Artificial Sequence
  chemically synthesized
aaaagaagcaacagaagttcag

SEQ ID NO: 65920 - DNA, 22 bp, Artificial Sequence
  chemically synthesized
agagcaatggagtgacttgccc

SEQ ID NO: 65921 - DNA, 22 bp, Artificial Sequence
  chemically synthesized
gcccatggtcacacagccacta

SEQ ID NO: 65922 - DNA, 22 bp, Artificial Sequence
  chemically synthesized
cccatggtcacacagccactac

SEQ ID NO: 65923 - DNA, 22 bp, Artificial Sequence
  chemically synthesized
cttagtgaaggtggggtggaat

SEQ ID NO: 65924 - DNA, 22 bp, Artificial Sequence
  chemically synthesized
agtgaaggtggggtggaattcc

SEQ ID NO: 65925 - DNA, 22 bp, Artificial Sequence
  chemically synthesized
gtgaaggtggggtggaattcca

SEQ ID NO: 65926 - DNA, 22 bp, Artificial Sequence
  chemically synthesized
caaagctcatgttcctaatcac

SEQ ID NO: 65927 - DNA, 22 bp, Artificial Sequence
  chemically synthesized
atgttcctaatcactccattat

SEQ ID NO: 65928 - DNA, 22 bp, Artificial Sequence
  chemically synthesized
ctaatcactccattataccatg

SEQ ID NO: 65929 - DNA, 22 bp, Artificial Sequence
  chemically synthesized
atcactccattataccatgaaa

SEQ ID NO: 65930 - DNA, 22 bp, Artificial Sequence
  chemically synthesized
cattataccatgaaaggagaat

SEQ ID NO: 65931 - DNA, 22 bp, Artificial Sequence
  chemically synthesized
taccatgaaaggagaataatga

SEQ ID NO: 65932 - DNA, 22 bp, Artificial Sequence
  chemically synthesized
tgtagtaatagtctaaggataa

SEQ ID NO: 65933 - DNA, 22 bp, Artificial Sequence
  chemically synthesized
gtagtaatagtctaaggataat

SEQ ID NO: 65934 - DNA, 22 bp, Artificial Sequence
  chemically synthesized
tagtaatagtctaaggataatt

SEQ ID NO: 65935 - DNA, 22 bp, Artificial Sequence
  chemically synthesized
aggataattcaagaatgaatag

SEQ ID NO: 65936 - DNA, 22 bp, Artificial Sequence
  chemically synthesized
aagaatgaataggtgtatacac

SEQ ID NO: 65937 - DNA, 22 bp, Artificial Sequence
  chemically synthesized
tgtctctgtttcaaaacccctt

SEQ ID NO: 65938 - DNA, 22 bp, Artificial Sequence
  chemically synthesized
tctctgtttcaaaaccccttta

SEQ ID NO: 65939 - DNA, 22 bp, Artificial Sequence
  chemically synthesized
tgtttcaaaacccctttataat

SEQ ID NO: 65940 - DNA, 22 bp, Artificial Sequence
  chemically synthesized
tttcaaaacccctttataattc

SEQ ID NO: 65941 - DNA, 22 bp, Artificial Sequence
  chemically synthesized
caaaacccctttataattctca

SEQ ID NO: 65942 - DNA, 22 bp, Artificial Sequence
  chemically synthesized
aaaacccctttataattctcag

SEQ ID NO: 65943 - DNA, 22 bp, Artificial Sequence
  chemically synthesized
tataattctcagaccagcttta

SEQ ID NO: 65944 - DNA, 22 bp, Artificial Sequence
  chemically synthesized
ataattctcagaccagctttat

SEQ ID NO: 65945 - DNA, 22 bp, Artificial Sequence
  chemically synthesized
taattctcagaccagctttatc

SEQ ID NO: 65946 - DNA, 22 bp, Artificial Sequence
  chemically synthesized
tcagaccagctttatccccaaa

SEQ ID NO: 65947 - DNA, 22 bp, Artificial Sequence
  chemically synthesized
agaccagctttatccccaaagt

SEQ ID NO: 65948 - DNA, 22 bp, Artificial Sequence
  chemically synthesized
tatccccaaagtctttctgtgt

SEQ ID NO: 65949 - DNA, 22 bp, Artificial Sequence
  chemically synthesized
atccccaaagtctttctgtgtt

SEQ ID NO: 65950 - DNA, 22 bp, Artificial Sequence
  chemically synthesized
tccccaaagtctttctgtgttc

SEQ ID NO: 65951 - DNA, 22 bp, Artificial Sequence
  chemically synthesized
tctgtgttcagctaataagtga

SEQ ID NO: 65952 - DNA, 22 bp, Artificial Sequence
  chemically synthesized
ctgtgttcagctaataagtgag

SEQ ID NO: 65953 - DNA, 22 bp, Artificial Sequence
  chemically synthesized
tgtgttcagctaataagtgaga

SEQ ID NO: 65954 - DNA, 22 bp, Artificial Sequence
  chemically synthesized
tgttcagctaataagtgagaga

SEQ ID NO: 65955 - DNA, 22 bp, Artificial Sequence
  chemically synthesized
agctaataagtgagagattcct

SEQ ID NO: 65956 - DNA, 22 bp, Artificial Sequence
  chemically synthesized
ataagtgagagattccttgctt

SEQ ID NO: 65957 - DNA, 22 bp, Artificial Sequence
  chemically synthesized
cttgcttgtctgattctcagca

SEQ ID NO: 65958 - DNA, 22 bp, Artificial Sequence
  chemically synthesized
gcttgtctgattctcagcaaaa

SEQ ID NO: 65959 - DNA, 22 bp, Artificial Sequence
  chemically synthesized
cttgtctgattctcagcaaaaa

SEQ ID NO: 65960 - DNA, 22 bp, Artificial Sequence
  chemically synthesized
gtctgattctcagcaaaaactg

SEQ ID NO: 65961 - DNA, 22 bp, Artificial Sequence
  chemically synthesized
tctgattctcagcaaaaactgt

SEQ ID NO: 65962 - DNA, 22 bp, Artificial Sequence
  chemically synthesized
attctcagcaaaaactgtcaag

SEQ ID NO: 65963 - DNA, 22 bp, Artificial Sequence
  chemically synthesized
tcagcaaaaactgtcaaggagg

SEQ ID NO: 65964 - DNA, 22 bp, Artificial Sequence
  chemically synthesized
agcaaaaactgtcaaggaggca

SEQ ID NO: 65965 - DNA, 22 bp, Artificial Sequence
  chemically synthesized
tcaaggaggcaggtgcaaggat

SEQ ID NO: 65966 - DNA, 22 bp, Artificial Sequence
  chemically synthesized
cactgttctgtgctgccctcat

SEQ ID NO: 65967 - DNA, 22 bp, Artificial Sequence
  chemically synthesized
actgttctgtgctgccctcatt

SEQ ID NO: 65968 - DNA, 22 bp, Artificial Sequence
  chemically synthesized
ttctgtgctgccctcattcgac

SEQ ID NO: 65969 - DNA, 22 bp, Artificial Sequence
  chemically synthesized
tgtgctgccctcattcgacgct

SEQ ID NO: 65970 - DNA, 22 bp, Artificial Sequence
  chemically synthesized
tgctgccctcattcgacgctcc

SEQ ID NO: 65971 - DNA, 22 bp, Artificial Sequence
  chemically synthesized
ccctcattcgacgctcctctta

SEQ ID NO: 65972 - DNA, 22 bp, Artificial Sequence
  chemically synthesized
attcgacgctcctcttacatct

SEQ ID NO: 65973 - DNA, 22 bp, Artificial Sequence
  chemically synthesized
gacgctcctcttacatctccca

SEQ ID NO: 65974 - DNA, 22 bp, Artificial Sequence
  chemically synthesized
ctcttacatctcccactctttc

SEQ ID NO: 65975 - DNA, 22 bp, Artificial Sequence
  chemically synthesized
ttacatctcccactctttcgca

SEQ ID NO: 65976 - DNA, 22 bp, Artificial Sequence
  chemically synthesized
acatctcccactctttcgcatt

SEQ ID NO: 65977 - DNA, 22 bp, Artificial Sequence
  chemically synthesized
catctcccactctttcgcattt

SEQ ID NO: 65978 - DNA, 22 bp, Artificial Sequence
  chemically synthesized
ccactctttcgcatttggacct

SEQ ID NO: 65979 - DNA, 22 bp, Artificial Sequence
  chemically synthesized
tttcgcatttggacctacttaa

SEQ ID NO: 65980 - DNA, 22 bp, Artificial Sequence
  chemically synthesized
tcgcatttggacctacttaacc

SEQ ID NO: 65981 - DNA, 22 bp, Artificial Sequence
  chemically synthesized
cgcatttggacctacttaacca

SEQ ID NO: 65982 - DNA, 22 bp, Artificial Sequence
  chemically synthesized
gcatttggacctacttaaccac

SEQ ID NO: 65983 - DNA, 22 bp, Artificial Sequence
  chemically synthesized
ggacctacttaaccacacaaca

SEQ ID NO: 65984 - DNA, 22 bp, Artificial Sequence
  chemically synthesized
gacctacttaaccacacaacag

SEQ ID NO: 65985 - DNA, 22 bp, Artificial Sequence
  chemically synthesized
cttaaccacacaacagccctgg

SEQ ID NO: 65986 - DNA, 22 bp, Artificial Sequence
  chemically synthesized
aaccacacaacagccctggggc

SEQ ID NO: 65987 - DNA, 22 bp, Artificial Sequence
  chemically synthesized
accacacaacagccctggggcc

SEQ ID NO: 65988 - DNA, 22 bp, Artificial Sequence
  chemically synthesized
gggccacagctgctcactaaag

SEQ ID NO: 65989 - DNA, 22 bp, Artificial Sequence
  chemically synthesized
ctcactaaagacaaggcagaag

SEQ ID NO: 65990 - DNA, 22 bp, Artificial Sequence
  chemically synthesized
actaaagacaaggcagaagcca

SEQ ID NO: 65991 - DNA, 22 bp, Artificial Sequence
  chemically synthesized
aagacaaggcagaagccactgc

SEQ ID NO: 65992 - DNA, 22 bp, Artificial Sequence
  chemically synthesized
cagtaacactgggagagaggag

SEQ ID NO: 65993 - DNA, 22 bp, Artificial Sequence
  chemically synthesized
ggagagaggagaaactggtctg

SEQ ID NO: 65994 - DNA, 22 bp, Artificial Sequence
  chemically synthesized
gtctgtggcttctaggagcttc

SEQ ID NO: 65995 - DNA, 22 bp, Artificial Sequence
  chemically synthesized
tggcttctaggagcttcagtgt

SEQ ID NO: 65996 - DNA, 22 bp, Artificial Sequence
  chemically synthesized
ctaggagcttcagtgtgttttt

SEQ ID NO: 65997 - DNA, 22 bp, Artificial Sequence
  chemically synthesized
taggagcttcagtgtgtttttc

SEQ ID NO: 65998 - DNA, 22 bp, Artificial Sequence
  chemically synthesized
ggagcttcagtgtgtttttccc

SEQ ID NO: 65999 - DNA, 22 bp, Artificial Sequence
  chemically synthesized
cagtgtgtttttccccaaggag

SEQ ID NO: 66000 - DNA, 22 bp, Artificial Sequence
  chemically synthesized
agtgtgtttttccccaaggaga

SEQ ID NO: 66001 - DNA, 22 bp, Artificial Sequence
  chemically synthesized
ttccccaaggagatgcagcctt

SEQ ID NO: 66002 - DNA, 22 bp, Artificial Sequence
  chemically synthesized
tccccaaggagatgcagccttt

SEQ ID NO: 66003 - DNA, 22 bp, Artificial Sequence
  chemically synthesized
ccccaaggagatgcagccttta

SEQ ID NO: 66004 - DNA, 22 bp, Artificial Sequence
  chemically synthesized
cccaaggagatgcagcctttac

SEQ ID NO: 66005 - DNA, 22 bp, Artificial Sequence
  chemically synthesized
tacctgagggtcatatttgagg

SEQ ID NO: 66006 - DNA, 22 bp, Artificial Sequence
  chemically synthesized
acctgagggtcatatttgaggc

SEQ ID NO: 66007 - DNA, 22 bp, Artificial Sequence
  chemically synthesized
cctgagggtcatatttgaggca

SEQ ID NO: 66008 - DNA, 22 bp, Artificial Sequence
  chemically synthesized
agggtcatatttgaggcaacat

SEQ ID NO: 66009 - DNA, 22 bp, Artificial Sequence
  chemically synthesized
gaggcaacatggcgagaaaggc

SEQ ID NO: 66010 - DNA, 22 bp, Artificial Sequence
  chemically synthesized
aggcaacatggcgagaaaggca

SEQ ID NO: 66011 - DNA, 22 bp, Artificial Sequence
  chemically synthesized
agaatttcctgaagacagtgtt

SEQ ID NO: 66012 - DNA, 22 bp, Artificial Sequence
  chemically synthesized
cctgaagacagtgttcatgttc

SEQ ID NO: 66013 - DNA, 22 bp, Artificial Sequence
  chemically synthesized
ctgaagacagtgttcatgttca

SEQ ID NO: 66014 - DNA, 22 bp, Artificial Sequence
  chemically synthesized
aagacagtgttcatgttcaaca

SEQ ID NO: 66015 - DNA, 22 bp, Artificial Sequence
  chemically synthesized
atgttcaacaggtggccctgag

SEQ ID NO: 66016 - DNA, 22 bp, Artificial Sequence
  chemically synthesized
aacaggtggccctgagccctcc

SEQ ID NO: 66017 - DNA, 22 bp, Artificial Sequence
  chemically synthesized
agccctccttacacaatgaggt

SEQ ID NO: 66018 - DNA, 22 bp, Artificial Sequence
  chemically synthesized
cttacacaatgaggtcaagtag

SEQ ID NO: 66019 - DNA, 22 bp, Artificial Sequence
  chemically synthesized
acacaatgaggtcaagtagaga

SEQ ID NO: 66020 - DNA, 22 bp, Artificial Sequence
  chemically synthesized
cacaatgaggtcaagtagagag

SEQ ID NO: 66021 - DNA, 22 bp, Artificial Sequence
  chemically synthesized
acatgcaagagggtgtccttcc

SEQ ID NO: 66022 - DNA, 22 bp, Artificial Sequence
  chemically synthesized
catgcaagagggtgtccttccc

SEQ ID NO: 66023 - DNA, 22 bp, Artificial Sequence
  chemically synthesized
ccccccccatcctcctgctcct

SEQ ID NO: 66024 - DNA, 22 bp, Artificial Sequence
  chemically synthesized
cccccccatcctcctgctcctt

SEQ ID NO: 66025 - DNA, 22 bp, Artificial Sequence
  chemically synthesized
ctgctccttaaaatcttgcatc

SEQ ID NO: 66026 - DNA, 22 bp, Artificial Sequence
  chemically synthesized
ctccttaaaatcttgcatctcc

SEQ ID NO: 66027 - DNA, 22 bp, Artificial Sequence
  chemically synthesized
cttaaaatcttgcatctccaat

SEQ ID NO: 66028 - DNA, 22 bp, Artificial Sequence
  chemically synthesized
aaaatcttgcatctccaatgga

SEQ ID NO: 66029 - DNA, 22 bp, Artificial Sequence
  chemically synthesized
aaatcttgcatctccaatggac

SEQ ID NO: 66030 - DNA, 22 bp, Artificial Sequence
  chemically synthesized
gcatctccaatggacttacagg

SEQ ID NO: 66031 - DNA, 22 bp, Artificial Sequence
  chemically synthesized
catctccaatggacttacagga

SEQ ID NO: 66032 - DNA, 22 bp, Artificial Sequence
  chemically synthesized
caatggacttacaggaagaaaa

SEQ ID NO: 66033 - DNA, 22 bp, Artificial Sequence
  chemically synthesized
acaggaagaaaaagaaaaggcc

SEQ ID NO: 66034 - DNA, 22 bp, Artificial Sequence
  chemically synthesized
caggaagaaaaagaaaaggcca

SEQ ID NO: 66035 - DNA, 22 bp, Artificial Sequence
  chemically synthesized
atgcttccccttgaaggaaaga

SEQ ID NO: 66036 - DNA, 22 bp, Artificial Sequence
  chemically synthesized
ccccttgaaggaaagagcaaaa

SEQ ID NO: 66037 - DNA, 22 bp, Artificial Sequence
  chemically synthesized
cccttgaaggaaagagcaaaat

SEQ ID NO: 66038 - DNA, 22 bp, Artificial Sequence
  chemically synthesized
gaaggaaagagcaaaataataa

SEQ ID NO: 66039 - DNA, 22 bp, Artificial Sequence
  chemically synthesized
aaggaaagagcaaaataataat

SEQ ID NO: 66040 - DNA, 22 bp, Artificial Sequence
  chemically synthesized
gaacaaagcagcaagttcaagg

SEQ ID NO: 66041 - DNA, 22 bp, Artificial Sequence
  chemically synthesized
aaggatcaggcttcagttctgt

SEQ ID NO: 66042 - DNA, 22 bp, Artificial Sequence
  chemically synthesized
cagttctgtaggttcacttgga

SEQ ID NO: 66043 - DNA, 22 bp, Artificial Sequence
  chemically synthesized
agttctgtaggttcacttggaa

SEQ ID NO: 66044 - DNA, 22 bp, Artificial Sequence
  chemically synthesized
tgtaggttcacttggaagttat

SEQ ID NO: 66045 - DNA, 22 bp, Artificial Sequence
  chemically synthesized
taggttcacttggaagttatgt

SEQ ID NO: 66046 - DNA, 22 bp, Artificial Sequence
  chemically synthesized
acttggaagttatgtaaaacta

SEQ ID NO: 66047 - DNA, 22 bp, Artificial Sequence
  chemically synthesized
ggaagttatgtaaaactaaagt

SEQ ID NO: 66048 - DNA, 22 bp, Artificial Sequence
  chemically synthesized
gaagttatgtaaaactaaagtg

SEQ ID NO: 66049 - DNA, 22 bp, Artificial Sequence
  chemically synthesized
tgtaaaactaaagtgacaaaat

SEQ ID NO: 66050 - DNA, 22 bp, Artificial Sequence
  chemically synthesized
aagtgacaaaatgcactggttt

SEQ ID NO: 66051 - DNA, 22 bp, Artificial Sequence
  chemically synthesized
gtttgttttggactttccttgg

SEQ ID NO: 66052 - DNA, 22 bp, Artificial Sequence
  chemically synthesized
gttttggactttccttggttta

SEQ ID NO: 66053 - DNA, 22 bp, Artificial Sequence
  chemically synthesized
ttttggactttccttggtttag

SEQ ID NO: 66054 - DNA, 22 bp, Artificial Sequence
  chemically synthesized
tggactttccttggtttagcac

SEQ ID NO: 66055 - DNA, 22 bp, Artificial Sequence
  chemically synthesized
ggactttccttggtttagcacc

SEQ ID NO: 66056 - DNA, 22 bp, Artificial Sequence
  chemically synthesized
gactttccttggtttagcaccg

SEQ ID NO: 66057 - DNA, 22 bp, Artificial Sequence
  chemically synthesized
tccttggtttagcaccgagagt

SEQ ID NO: 66058 - DNA, 22 bp, Artificial Sequence
  chemically synthesized
ccttggtttagcaccgagagtc

SEQ ID NO: 66059 - DNA, 22 bp, Artificial Sequence
  chemically synthesized
cttggtttagcaccgagagtct

SEQ ID NO: 66060 - DNA, 22 bp, Artificial Sequence
  chemically synthesized
ggtttagcaccgagagtctacg

SEQ ID NO: 66061 - DNA, 22 bp, Artificial Sequence
  chemically synthesized
gtttagcaccgagagtctacgg

SEQ ID NO: 66062 - DNA, 22 bp, Artificial Sequence
  chemically synthesized
agcaccgagagtctacggtgaa

SEQ ID NO: 66063 - DNA, 22 bp, Artificial Sequence
  chemically synthesized
gcaccgagagtctacggtgaac

SEQ ID NO: 66064 - DNA, 22 bp, Artificial Sequence
  chemically synthesized
cggtgaacagagttggttggtt

SEQ ID NO: 66065 - DNA, 22 bp, Artificial Sequence
  chemically synthesized
gttggttgcccataacctccaa

SEQ ID NO: 66066 - DNA, 22 bp, Artificial Sequence
  chemically synthesized
gttgcccataacctccaaagca

SEQ ID NO: 66067 - DNA, 22 bp, Artificial Sequence
  chemically synthesized
cccataacctccaaagcagagt

SEQ ID NO: 66068 - DNA, 22 bp, Artificial Sequence
  chemically synthesized
caaagcagagttagaaaatttc

SEQ ID NO: 66069 - DNA, 22 bp, Artificial Sequence
  chemically synthesized
gaaaatttctctgaggtcaata

SEQ ID NO: 66070 - DNA, 22 bp, Artificial Sequence
  chemically synthesized
ctctgaggtcaataatttataa

SEQ ID NO: 66071 - DNA, 22 bp, Artificial Sequence
  chemically synthesized
tctgaggtcaataatttataaa

SEQ ID NO: 66072 - DNA, 22 bp, Artificial Sequence
  chemically synthesized
tgaggtcaataatttataaatg

SEQ ID NO: 66073 - DNA, 22 bp, Artificial Sequence
  chemically synthesized
aggtcaataatttataaatgga

SEQ ID NO: 66074 - DNA, 22 bp, Artificial Sequence
  chemically synthesized
ataaatggaatccttttcaatt

SEQ ID NO: 66075 - DNA, 22 bp, Artificial Sequence
  chemically synthesized
taaatggaatccttttcaattt

SEQ ID NO: 66076 - DNA, 22 bp, Artificial Sequence
  chemically synthesized
ttcaatttttcttggaaaagta

SEQ ID NO: 66077 - DNA, 22 bp, Artificial Sequence
  chemically synthesized
tcaatttttcttggaaaagtaa

SEQ ID NO: 66078 - DNA, 22 bp, Artificial Sequence
  chemically synthesized
caatttttcttggaaaagtaag

SEQ ID NO: 66079 - DNA, 22 bp, Artificial Sequence
  chemically synthesized
aatttttcttggaaaagtaagc

SEQ ID NO: 66080 - DNA, 22 bp, Artificial Sequence
  chemically synthesized
ttcttggaaaagtaagctggtc

SEQ ID NO: 66081 - DNA, 22 bp, Artificial Sequence
  chemically synthesized
tcttggaaaagtaagctggtca

SEQ ID NO: 66082 - DNA, 22 bp, Artificial Sequence
  chemically synthesized
cttggaaaagtaagctggtcaa

SEQ ID NO: 66083 - DNA, 22 bp, Artificial Sequence
  chemically synthesized
ttggaaaagtaagctggtcaaa

SEQ ID NO: 66084 - DNA, 22 bp, Artificial Sequence
  chemically synthesized
ggaaaagtaagctggtcaaatg

SEQ ID NO: 66085 - DNA, 22 bp, Artificial Sequence
  chemically synthesized
gaaaagtaagctggtcaaatgg

SEQ ID NO: 66086 - DNA, 22 bp, Artificial Sequence
  chemically synthesized
gtcaaatggactcatcaaagaa

SEQ ID NO: 66087 - DNA, 22 bp, Artificial Sequence
  chemically synthesized
atcaaagaatggtgaaggtgtg

SEQ ID NO: 66088 - DNA, 22 bp, Artificial Sequence
  chemically synthesized
agaccagataagggaggagctt

SEQ ID NO: 66089 - DNA, 22 bp, Artificial Sequence
  chemically synthesized
tctctctctctctctctctctt

SEQ ID NO: 66090 - DNA, 22 bp, Artificial Sequence
  chemically synthesized
ctctctctctctctctctcttc

SEQ ID NO: 66091 - DNA, 22 bp, Artificial Sequence
  chemically synthesized
tctctctctctctctctcttca

SEQ ID NO: 66092 - DNA, 22 bp, Artificial Sequence
  chemically synthesized
tctctctctctctctcttcaaa

SEQ ID NO: 66093 - DNA, 22 bp, Artificial Sequence
  chemically synthesized
tctctctctctctcttcaaatc

SEQ ID NO: 66094 - DNA, 22 bp, Artificial Sequence
  chemically synthesized
tctctctctctcttcaaatcat

SEQ ID NO: 66095 - DNA, 22 bp, Artificial Sequence
  chemically synthesized
tctctctctcttcaaatcatat

SEQ ID NO: 66096 - DNA, 22 bp, Artificial Sequence
  chemically synthesized
tctctctcttcaaatcatattt

SEQ ID NO: 66097 - DNA, 22 bp, Artificial Sequence
  chemically synthesized
tctctcttcaaatcatatttaa

SEQ ID NO: 66098 - DNA, 22 bp, Artificial Sequence
  chemically synthesized
tctcttcaaatcatatttaaca

SEQ ID NO: 66099 - DNA, 22 bp, Artificial Sequence
  chemically synthesized
tcttcaaatcatatttaacata

SEQ ID NO: 66100 - DNA, 22 bp, Artificial Sequence
  chemically synthesized
ttcaaatcatatttaacataga

SEQ ID NO: 66101 - DNA, 22 bp, Artificial Sequence
  chemically synthesized
caaatcatatttaacatagatt

SEQ ID NO: 66102 - DNA, 22 bp, Artificial Sequence
  chemically synthesized
aaatcatatttaacatagattt

SEQ ID NO: 66103 - DNA, 22 bp, Artificial Sequence
  chemically synthesized
aacatagatttctgtattgctc

SEQ ID NO: 66104 - DNA, 22 bp, Artificial Sequence
  chemically synthesized
acatagatttctgtattgctca

SEQ ID NO: 66105 - DNA, 22 bp, Artificial Sequence
  chemically synthesized
ctgtattgctcaatttttcatc

SEQ ID NO: 66106 - DNA, 22 bp, Artificial Sequence
  chemically synthesized
tgtattgctcaatttttcatca

SEQ ID NO: 66107 - DNA, 22 bp, Artificial Sequence
  chemically synthesized
tattgctcaatttttcatcagt

SEQ ID NO: 66108 - DNA, 22 bp, Artificial Sequence
  chemically synthesized
ctcaatttttcatcagtcatgt

SEQ ID NO: 66109 - DNA, 22 bp, Artificial Sequence
  chemically synthesized
aatttttcatcagtcatgtata

SEQ ID NO: 66110 - DNA, 22 bp, Artificial Sequence
  chemically synthesized
ttcatcagtcatgtatactttt

SEQ ID NO: 66111 - DNA, 22 bp, Artificial Sequence
  chemically synthesized
tcatcagtcatgtatactttta

SEQ ID NO: 66112 - DNA, 22 bp, Artificial Sequence
  chemically synthesized
catcagtcatgtatacttttat

SEQ ID NO: 66113 - DNA, 22 bp, Artificial Sequence
  chemically synthesized
atcagtcatgtatacttttata

SEQ ID NO: 66114 - DNA, 22 bp, Artificial Sequence
  chemically synthesized
ttataattaggaaaaatcacaa

SEQ ID NO: 66115 - DNA, 22 bp, Artificial Sequence
  chemically synthesized
tataattaggaaaaatcacaat

SEQ ID NO: 66116 - DNA, 22 bp, Artificial Sequence
  chemically synthesized
ataattaggaaaaatcacaata

SEQ ID NO: 66117 - DNA, 22 bp, Artificial Sequence
  chemically synthesized
taattaggaaaaatcacaatat

SEQ ID NO: 66118 - DNA, 22 bp, Artificial Sequence
  chemically synthesized
ggaaaaatcacaatatttacaa

SEQ ID NO: 66119 - DNA, 22 bp, Artificial Sequence
  chemically synthesized
acaaataaagtacttaatgaat

SEQ ID NO: 66120 - DNA, 22 bp, Artificial Sequence
  chemically synthesized
caaataaagtacttaatgaatt

SEQ ID NO: 66121 - DNA, 22 bp, Artificial Sequence
  chemically synthesized
aatgaattttaaatgagacata

SEQ ID NO: 66122 - DNA, 22 bp, Artificial Sequence
  chemically synthesized
atgaattttaaatgagacataa

SEQ ID NO: 66123 - DNA, 22 bp, Artificial Sequence
  chemically synthesized
taaatgagacataacaaaatat

SEQ ID NO: 66124 - DNA, 22 bp, Artificial Sequence
  chemically synthesized
aaatgagacataacaaaatatt

SEQ ID NO: 66125 - DNA, 22 bp, Artificial Sequence
  chemically synthesized
aatgagacataacaaaatattg

SEQ ID NO: 66126 - DNA, 22 bp, Artificial Sequence
  chemically synthesized
ggtgcctatgaagatacagttt

SEQ ID NO: 66127 - DNA, 22 bp, Artificial Sequence
  chemically synthesized
tgaagatacagttttctaattg

SEQ ID NO: 66128 - DNA, 22 bp, Artificial Sequence
  chemically synthesized
tctaattgctctgtttgataaa

SEQ ID NO: 66129 - DNA, 22 bp, Artificial Sequence
  chemically synthesized
ctaattgctctgtttgataaaa

SEQ ID NO: 66130 - DNA, 22 bp, Artificial Sequence
  chemically synthesized
taattgctctgtttgataaaag

SEQ ID NO: 66131 - DNA, 22 bp, Artificial Sequence
  chemically synthesized
attgctctgtttgataaaagtc

SEQ ID NO: 66132 - DNA, 22 bp, Artificial Sequence
  chemically synthesized
ctctgtttgataaaagtctgga

SEQ ID NO: 66133 - DNA, 22 bp, Artificial Sequence
  chemically synthesized
tgtttgataaaagtctggattt

SEQ ID NO: 66134 - DNA, 22 bp, Artificial Sequence
  chemically synthesized
tttgataaaagtctggatttgt

SEQ ID NO: 66135 - DNA, 22 bp, Artificial Sequence
  chemically synthesized
gataaaagtctggatttgtata

SEQ ID NO: 66136 - DNA, 22 bp, Artificial Sequence
  chemically synthesized
ataaaagtctggatttgtatac

SEQ ID NO: 66137 - DNA, 22 bp, Artificial Sequence
  chemically synthesized
gatttgtatacatcaccagtat

SEQ ID NO: 66138 - DNA, 22 bp, Artificial Sequence
  chemically synthesized
gtatacatcaccagtatttcca

SEQ ID NO: 66139 - DNA, 22 bp, Artificial Sequence
  chemically synthesized
tatacatcaccagtatttccat

SEQ ID NO: 66140 - DNA, 22 bp, Artificial Sequence
  chemically synthesized
ccatgtttctcccaatttcacc

SEQ ID NO: 66141 - DNA, 22 bp, Artificial Sequence
  chemically synthesized
catgtttctcccaatttcacct

SEQ ID NO: 66142 - DNA, 22 bp, Artificial Sequence
  chemically synthesized
ctcccaatttcacctcccaatt

SEQ ID NO: 66143 - DNA, 22 bp, Artificial Sequence
  chemically synthesized
tcccaatttcacctcccaattt

SEQ ID NO: 66144 - DNA, 22 bp, Artificial Sequence
  chemically synthesized
ccaatttcacctcccaatttct

SEQ ID NO: 66145 - DNA, 22 bp, Artificial Sequence
  chemically synthesized
cacctcccaatttctcccatcc

SEQ ID NO: 66146 - DNA, 22 bp, Artificial Sequence
  chemically synthesized
acctcccaatttctcccatccg

SEQ ID NO: 66147 - DNA, 22 bp, Artificial Sequence
  chemically synthesized
ccaatttctcccatccgtgttg

SEQ ID NO: 66148 - DNA, 22 bp, Artificial Sequence
  chemically synthesized
ctcccatccgtgttgaaatcaa

SEQ ID NO: 66149 - DNA, 22 bp, Artificial Sequence
  chemically synthesized
tcccatccgtgttgaaatcaag

SEQ ID NO: 66150 - DNA, 22 bp, Artificial Sequence
  chemically synthesized
ccatccgtgttgaaatcaagtc

SEQ ID NO: 66151 - DNA, 22 bp, Artificial Sequence
  chemically synthesized
aaatcaagtcacttgtctccta

SEQ ID NO: 66152 - DNA, 22 bp, Artificial Sequence
  chemically synthesized
gtctcctattgagaagtaagac

SEQ ID NO: 66153 - DNA, 22 bp, Artificial Sequence
  chemically synthesized
tctcctattgagaagtaagacc

SEQ ID NO: 66154 - DNA, 22 bp, Artificial Sequence
  chemically synthesized
ctattgagaagtaagacctccc

SEQ ID NO: 66155 - DNA, 22 bp, Artificial Sequence
  chemically synthesized
ttgagaagtaagacctcccttg

SEQ ID NO: 66156 - DNA, 22 bp, Artificial Sequence
  chemically synthesized
agaagtaagacctcccttggat

SEQ ID NO: 66157 - DNA, 22 bp, Artificial Sequence
  chemically synthesized
ccttggatcacctggaaaaaac

SEQ ID NO: 66158 - DNA, 22 bp, Artificial Sequence
  chemically synthesized
ggatcacctggaaaaaacaagt

SEQ ID NO: 66159 - DNA, 22 bp, Artificial Sequence
  chemically synthesized
gatcacctggaaaaaacaagtt

SEQ ID NO: 66160 - DNA, 22 bp, Artificial Sequence
  chemically synthesized
gaaaaaacaagttaaataatgg

SEQ ID NO: 66161 - DNA, 22 bp, Artificial Sequence
  chemically synthesized
aataatggcccattgtccctct

SEQ ID NO: 66162 - DNA, 22 bp, Artificial Sequence
  chemically synthesized
tccctctggacactaacatttt

SEQ ID NO: 66163 - DNA, 22 bp, Artificial Sequence
  chemically synthesized
tggacactaacattttatccac

SEQ ID NO: 66164 - DNA, 22 bp, Artificial Sequence
  chemically synthesized
gacactaacattttatccactg

SEQ ID NO: 66165 - DNA, 22 bp, Artificial Sequence
  chemically synthesized
acattttatccactgtctttat

SEQ ID NO: 66166 - DNA, 22 bp, Artificial Sequence
  chemically synthesized
tatccactgtctttatttcaaa

SEQ ID NO: 66167 - DNA, 22 bp, Artificial Sequence
  chemically synthesized
atccactgtctttatttcaaat

SEQ ID NO: 66168 - DNA, 22 bp, Artificial Sequence
  chemically synthesized
tccactgtctttatttcaaatc

SEQ ID NO: 66169 - DNA, 22 bp, Artificial Sequence
  chemically synthesized
tctttatttcaaatcttttcca

SEQ ID NO: 66170 - DNA, 22 bp, Artificial Sequence
  chemically synthesized
tatttcaaatcttttccacatg

SEQ ID NO: 66171 - DNA, 22 bp, Artificial Sequence
  chemically synthesized
atttcaaatcttttccacatga

SEQ ID NO: 66172 - DNA, 22 bp, Artificial Sequence
  chemically synthesized
tttcaaatcttttccacatgac

SEQ ID NO: 66173 - DNA, 22 bp, Artificial Sequence
  chemically synthesized
caaatcttttccacatgacaag

SEQ ID NO: 66174 - DNA, 22 bp, Artificial Sequence
  chemically synthesized
aaatcttttccacatgacaagc

SEQ ID NO: 66175 - DNA, 22 bp, Artificial Sequence
  chemically synthesized
ttccacatgacaagcaaacctt

SEQ ID NO: 66176 - DNA, 22 bp, Artificial Sequence
  chemically synthesized
tccacatgacaagcaaacctta

SEQ ID NO: 66177 - DNA, 22 bp, Artificial Sequence
  chemically synthesized
ccacatgacaagcaaaccttaa

SEQ ID NO: 66178 - DNA, 22 bp, Artificial Sequence
  chemically synthesized
cacatgacaagcaaaccttaac

SEQ ID NO: 66179 - DNA, 22 bp, Artificial Sequence
  chemically synthesized
aacttgcatcatgaaatagcaa

SEQ ID NO: 66180 - DNA, 22 bp, Artificial Sequence
  chemically synthesized
acttgcatcatgaaatagcaaa

SEQ ID NO: 66181 - DNA, 22 bp, Artificial Sequence
  chemically synthesized
gcatcatgaaatagcaaagaca

SEQ ID NO: 66182 - DNA, 22 bp, Artificial Sequence
  chemically synthesized
catcatgaaatagcaaagacag

SEQ ID NO: 66183 - DNA, 22 bp, Artificial Sequence
  chemically synthesized
cctaggatccatgttgttccaa

SEQ ID NO: 66184 - DNA, 22 bp, Artificial Sequence
  chemically synthesized
ggatccatgttgttccaagcaa

SEQ ID NO: 66185 - DNA, 22 bp, Artificial Sequence
  chemically synthesized
ttccaagcaaattaaaaataaa

SEQ ID NO: 66186 - DNA, 22 bp, Artificial Sequence
  chemically synthesized
caagcaaattaaaaataaaaca

SEQ ID NO: 66187 - DNA, 22 bp, Artificial Sequence
  chemically synthesized
aaaataaaacactgctgacatg

SEQ ID NO: 66188 - DNA, 22 bp, Artificial Sequence
  chemically synthesized
ctgacatgtattggccaattgt

SEQ ID NO: 66189 - DNA, 22 bp, Artificial Sequence
  chemically synthesized
acatgtattggccaattgttgc

SEQ ID NO: 66190 - DNA, 22 bp, Artificial Sequence
  chemically synthesized
gccaattgttgcaagagacaaa

SEQ ID NO: 66191 - DNA, 22 bp, Artificial Sequence
  chemically synthesized
ttgcaagagacaaagaacgaaa

SEQ ID NO: 66192 - DNA, 22 bp, Artificial Sequence
  chemically synthesized
caagagacaaagaacgaaaagg

SEQ ID NO: 66193 - DNA, 22 bp, Artificial Sequence
  chemically synthesized
gagcctggacaacttgatgcca

SEQ ID NO: 66194 - DNA, 22 bp, Artificial Sequence
  chemically synthesized
gacaacttgatgccaagctcca

SEQ ID NO: 66195 - DNA, 22 bp, Artificial Sequence
  chemically synthesized
gatgccaagctccagccttgag

SEQ ID NO: 66196 - DNA, 22 bp, Artificial Sequence
  chemically synthesized
atgccaagctccagccttgagc

SEQ ID NO: 66197 - DNA, 22 bp, Artificial Sequence
  chemically synthesized
cagccttgagcgcagacctccc

SEQ ID NO: 66198 - DNA, 22 bp, Artificial Sequence
  chemically synthesized
gagcgcagacctcccagactag

SEQ ID NO: 66199 - DNA, 22 bp, Artificial Sequence
  chemically synthesized
agcgcagacctcccagactagt

SEQ ID NO: 66200 - DNA, 22 bp, Artificial Sequence
  chemically synthesized
ccagactagtgattagctgtgg

SEQ ID NO: 66201 - DNA, 22 bp, Artificial Sequence
  chemically synthesized
gtgattagctgtggttagtcct

SEQ ID NO: 66202 - DNA, 22 bp, Artificial Sequence
  chemically synthesized
gctgtggttagtccttgaagtg

SEQ ID NO: 66203 - DNA, 22 bp, Artificial Sequence
  chemically synthesized
tggttagtccttgaagtgccga

SEQ ID NO: 66204 - DNA, 22 bp, Artificial Sequence
  chemically synthesized
gtccttgaagtgccgacaggcc

SEQ ID NO: 66205 - DNA, 22 bp, Artificial Sequence
  chemically synthesized
gaagtgccgacaggcccttcac

SEQ ID NO: 66206 - DNA, 22 bp, Artificial Sequence
  chemically synthesized
aagtgccgacaggcccttcact

SEQ ID NO: 66207 - DNA, 22 bp, Artificial Sequence
  chemically synthesized
cactggccctgctcctccaggc

SEQ ID NO: 66208 - DNA, 22 bp, Artificial Sequence
  chemically synthesized
actggccctgctcctccaggca

SEQ ID NO: 66209 - DNA, 22 bp, Artificial Sequence
  chemically synthesized
gccctgctcctccaggcaatgt

SEQ ID NO: 66210 - DNA, 22 bp, Artificial Sequence
  chemically synthesized
ctcctccaggcaatgtgctccc

SEQ ID NO: 66211 - DNA, 22 bp, Artificial Sequence
  chemically synthesized
ctccaggcaatgtgctccctgc

SEQ ID NO: 66212 - DNA, 22 bp, Artificial Sequence
  chemically synthesized
caggcaatgtgctccctgcatc

SEQ ID NO: 66213 - DNA, 22 bp, Artificial Sequence
  chemically synthesized
cctgcatccctgctttcacctg

SEQ ID NO: 66214 - DNA, 22 bp, Artificial Sequence
  chemically synthesized
catccctgctttcacctgcctc

SEQ ID NO: 66215 - DNA, 22 bp, Artificial Sequence
  chemically synthesized
ctttcacctgcctctccatcca

SEQ ID NO: 66216 - DNA, 22 bp, Artificial Sequence
  chemically synthesized
tcacctgcctctccatccaagc

SEQ ID NO: 66217 - DNA, 22 bp, Artificial Sequence
  chemically synthesized
cacctgcctctccatccaagcc

SEQ ID NO: 66218 - DNA, 22 bp, Artificial Sequence
  chemically synthesized
acctgcctctccatccaagccc

SEQ ID NO: 66219 - DNA, 22 bp, Artificial Sequence
  chemically synthesized
cctctccatccaagccccaacc

SEQ ID NO: 66220 - DNA, 22 bp, Artificial Sequence
  chemically synthesized
tccatccaagccccaacccccc

SEQ ID NO: 66221 - DNA, 22 bp, Artificial Sequence
  chemically synthesized
catccaagccccaacccccctg

SEQ ID NO: 66222 - DNA, 22 bp, Artificial Sequence
  chemically synthesized
agcaggttgcctacacttattc

SEQ ID NO: 66223 - DNA, 22 bp, Artificial Sequence
  chemically synthesized
cctacacttattccccttggct

SEQ ID NO: 66224 - DNA, 22 bp, Artificial Sequence
  chemically synthesized
cacttattccccttggctccca

SEQ ID NO: 66225 - DNA, 22 bp, Artificial Sequence
  chemically synthesized
attccccttggctcccaaaggc

SEQ ID NO: 66226 - DNA, 22 bp, Artificial Sequence
  chemically synthesized
ttccccttggctcccaaaggcc

SEQ ID NO: 66227 - DNA, 22 bp, Artificial Sequence
  chemically synthesized
cccttggctcccaaaggccctt

SEQ ID NO: 66228 - DNA, 22 bp, Artificial Sequence
  chemically synthesized
ggctcccaaaggcccttttaag

SEQ ID NO: 66229 - DNA, 22 bp, Artificial Sequence
  chemically synthesized
gctcccaaaggcccttttaaga

SEQ ID NO: 66230 - DNA, 22 bp, Artificial Sequence
  chemically synthesized
ccaaaggcccttttaagagacc

SEQ ID NO: 66231 - DNA, 22 bp, Artificial Sequence
  chemically synthesized
ttaagagaccttttcaaattca

SEQ ID NO: 66232 - DNA, 22 bp, Artificial Sequence
  chemically synthesized
taagagaccttttcaaattcaa

SEQ ID NO: 66233 - DNA, 22 bp, Artificial Sequence
  chemically synthesized
aagagaccttttcaaattcaat

SEQ ID NO: 66234 - DNA, 22 bp, Artificial Sequence
  chemically synthesized
agagaccttttcaaattcaatc

SEQ ID NO: 66235 - DNA, 22 bp, Artificial Sequence
  chemically synthesized
ttcaaattcaatctcttcccag

SEQ ID NO: 66236 - DNA, 22 bp, Artificial Sequence
  chemically synthesized
tcaaattcaatctcttcccaga

SEQ ID NO: 66237 - DNA, 22 bp, Artificial Sequence
  chemically synthesized
caaattcaatctcttcccagac

SEQ ID NO: 66238 - DNA, 22 bp, Artificial Sequence
  chemically synthesized
aaattcaatctcttcccagaca

SEQ ID NO: 66239 - DNA, 22 bp, Artificial Sequence
  chemically synthesized
aatctcttcccagacagcaatg

SEQ ID NO: 66240 - DNA, 22 bp, Artificial Sequence
  chemically synthesized
ttcccagacagcaatgagttcc

SEQ ID NO: 66241 - DNA, 22 bp, Artificial Sequence
  chemically synthesized
cccagacagcaatgagttccaa

SEQ ID NO: 66242 - DNA, 22 bp, Artificial Sequence
  chemically synthesized
ccagacagcaatgagttccaat

SEQ ID NO: 66243 - DNA, 22 bp, Artificial Sequence
  chemically synthesized
caattgctgataacaatcaaaa

SEQ ID NO: 66244 - DNA, 22 bp, Artificial Sequence
  chemically synthesized
ctgataacaatcaaaatctact

SEQ ID NO: 66245 - DNA, 22 bp, Artificial Sequence
  chemically synthesized
ataacaatcaaaatctactcct

SEQ ID NO: 66246 - DNA, 22 bp, Artificial Sequence
  chemically synthesized
ctcctgcagccatggtctgagt

SEQ ID NO: 66247 - DNA, 22 bp, Artificial Sequence
  chemically synthesized
ctgcagccatggtctgagtgtg

SEQ ID NO: 66248 - DNA, 22 bp, Artificial Sequence
  chemically synthesized
cagccatggtctgagtgtgtga

SEQ ID NO: 66249 - DNA, 22 bp, Artificial Sequence
  chemically synthesized
agtgtgtgaacgctgcattttg

SEQ ID NO: 66250 - DNA, 22 bp, Artificial Sequence
  chemically synthesized
cattttgagctcttatcataat

SEQ ID NO: 66251 - DNA, 22 bp, Artificial Sequence
  chemically synthesized
tgagctcttatcataattcagc

SEQ ID NO: 66252 - DNA, 22 bp, Artificial Sequence
  chemically synthesized
gagctcttatcataattcagca

SEQ ID NO: 66253 - DNA, 22 bp, Artificial Sequence
  chemically synthesized
agctcttatcataattcagcag

SEQ ID NO: 66254 - DNA, 22 bp, Artificial Sequence
  chemically synthesized
ttatcataattcagcagatgct

SEQ ID NO: 66255 - DNA, 22 bp, Artificial Sequence
  chemically synthesized
atcataattcagcagatgctgt

SEQ ID NO: 66256 - DNA, 22 bp, Artificial Sequence
  chemically synthesized
tcataattcagcagatgctgtt

SEQ ID NO: 66257 - DNA, 22 bp, Artificial Sequence
  chemically synthesized
agcagatgctgtttacggacat

SEQ ID NO: 66258 - DNA, 22 bp, Artificial Sequence
  chemically synthesized
tttacggacattgagattacat

SEQ ID NO: 66259 - DNA, 22 bp, Artificial Sequence
  chemically synthesized
acggacattgagattacataca

SEQ ID NO: 66260 - DNA, 22 bp, Artificial Sequence
  chemically synthesized
cggacattgagattacatacat

SEQ ID NO: 66261 - DNA, 22 bp, Artificial Sequence
  chemically synthesized
agattacatacataagcatgta

SEQ ID NO: 66262 - DNA, 22 bp, Artificial Sequence
  chemically synthesized
catacataagcatgtatctata

SEQ ID NO: 66263 - DNA, 22 bp, Artificial Sequence
  chemically synthesized
tacatctctaactagcaaaact

SEQ ID NO: 66264 - DNA, 22 bp, Artificial Sequence
  chemically synthesized
taactagcaaaactcttgtctt

SEQ ID NO: 66265 - DNA, 22 bp, Artificial Sequence
  chemically synthesized
actagcaaaactcttgtcttct

SEQ ID NO: 66266 - DNA, 22 bp, Artificial Sequence
  chemically synthesized
gcaaaactcttgtcttctaaca

SEQ ID NO: 66267 - DNA, 22 bp, Artificial Sequence
  chemically synthesized
ttgtcttctaacatcaccaatt

SEQ ID NO: 66268 - DNA, 22 bp, Artificial Sequence
  chemically synthesized
gtcttctaacatcaccaatttg

SEQ ID NO: 66269 - DNA, 22 bp, Artificial Sequence
  chemically synthesized
tcttctaacatcaccaatttga

SEQ ID NO: 66270 - DNA, 22 bp, Artificial Sequence
  chemically synthesized
ctaacatcaccaatttgaaagc

SEQ ID NO: 66271 - DNA, 22 bp, Artificial Sequence
  chemically synthesized
taacatcaccaatttgaaagcc

SEQ ID NO: 66272 - DNA, 22 bp, Artificial Sequence
  chemically synthesized
acatcaccaatttgaaagccag

SEQ ID NO: 66273 - DNA, 22 bp, Artificial Sequence
  chemically synthesized
gaaagccagaactagaagggaa

SEQ ID NO: 66274 - DNA, 22 bp, Artificial Sequence
  chemically synthesized
aaagccagaactagaagggaac

SEQ ID NO: 66275 - DNA, 22 bp, Artificial Sequence
  chemically synthesized
gaagggaacttagaggttactt

SEQ ID NO: 66276 - DNA, 22 bp, Artificial Sequence
  chemically synthesized
agaggttacttgccccaacgca

SEQ ID NO: 66277 - DNA, 22 bp, Artificial Sequence
  chemically synthesized
gaggttacttgccccaacgcat

SEQ ID NO: 66278 - DNA, 22 bp, Artificial Sequence
  chemically synthesized
cttgccccaacgcatgtgtttt

SEQ ID NO: 66279 - DNA, 22 bp, Artificial Sequence
  chemically synthesized
gccccaacgcatgtgttttatt

SEQ ID NO: 66280 - DNA, 22 bp, Artificial Sequence
  chemically synthesized
ccccaacgcatgtgttttattt

SEQ ID NO: 66281 - DNA, 22 bp, Artificial Sequence
  chemically synthesized
tatttatttattcctgaagggc

SEQ ID NO: 66282 - DNA, 22 bp, Artificial Sequence
  chemically synthesized
atttatttattcctgaagggca

SEQ ID NO: 66283 - DNA, 22 bp, Artificial Sequence
  chemically synthesized
tttatttattcctgaagggcaa

SEQ ID NO: 66284 - DNA, 22 bp, Artificial Sequence
  chemically synthesized
atttattcctgaagggcaaagt

SEQ ID NO: 66285 - DNA, 22 bp, Artificial Sequence
  chemically synthesized
tttattcctgaagggcaaagtg

SEQ ID NO: 66286 - DNA, 23 bp, Artificial Sequence
  chemically synthesized
  misc_feature (1)..(21): n is a, c, g, or t
nnnnnnnnnnnnnnnnnnnnnrg

SEQ ID NO: 66287 - protein, 9 aa, Artificial Sequence
  chemically synthesized
LAGLIDADG
